United States Patent Application Publication US 2025/0236852 A1 - sequence listing, part 2

SEQ ID NO: 2286 - DNA, 966 bp, unidentified
  source 1..966: mol_type = unassigned DNA; note = Bacteriophage uvig_374979 from the Index of /pub/databases/metagenomics/genome_sets/gut_phage_database (ebi.ac.uk)
aagaaaaaacgcaaggtggagggagctgataagcgcaccgccgatggttccgagttcgaaagccccaagaagaagaggaaagtctagttctgcagagggtgatgccattcgacgaacttgtttattgcagcttataatggttacaaataaagcaatagcatcacaaatttcacaaataaagcatttttttcactgcattctagttgtggtttgtccaaactcatcaatgtatcttagtaccgcattcatttcagtgagagcttactcatcagagttcgtattccccatgtgggatttgccggccataaaaaataggctgtgtcccggttgcgagacacagcttataaaaatctccaccagtaaatataattgcatatatgataacaaaaaaccgccccctgcgccaacaggagacggcccgaatgtaacagcctgcggggtacgcagacaatcacactacacaatgtgattatagcacctctcaggcctgtttgccaaatgtaaattaactgaaagaggtgttttattatgaaaaaagcagcactttatattcgtgtttccacggatgaacaggccaagacgtccgtatcagactaacgcttatccatgtccagaggaaaagggcaaaccctataagtatttccgtgtagaatttaactgaaccacaaaaaacaccaggcaggagctttcccgtctggtggttttatacatttattaagttttatgcatagcctttatgcaaaattatacccctggttttccagtacgccctcttttggtcattggaatgccagctttgcacagtgggcattcttctggcttgtaggtctgtacatccatatggagcaatgcagtgcttggtacataaaaagacagctctatagttctgctttcaggattttcgccctggaatcgtcgactgcacgatcaaacatcgatcgaagcttaatacagacgctggcttcg

SEQ ID NO: 2287 - DNA, 966 bp, unidentified
  source 1..966: mol_type = unassigned DNA; note = Bacteriophage uvig_140430 from the Index of /pub/databases/metagenomics/genome_sets/gut_phage_database (ebi.ac.uk)
aagaaaaaacgcaaggtggagggagctgataagcgcaccgccgatggttccgagttcgaaagccccaagaagaagaggaaagtctagttctgcagagggtgatgccattcgacgaacttgtttattgcagcttataatggttacaaataaagcaatagcatcacaaatttcacaaataaagcatttttttcactgcattctagttgtggtttgtccaaactcatcaatgtatcttagtaccgcattcatttcagtgagagcttactcatcagagttcgtgaacagcgaattattgatgacaattcgacacaaagcatttgcaaacaagggaatagaattattgtcatcgagggcatatgcaaaggtgggaaaccgctcggagagctgcttctcgaaatagcaacagacagaatcaataagaagttctattgatggtgcagactggacacatatcattcgcccatgtatattgatggcgtgagtgaatagttgttctggatgtgctgttttcaatttggagagataacaatgagaatacagaacattcacagagtcggaatttacctccggctttctcggacgtccgtatcagactaacgcttatccattcaggcagcatattactgtaaactataaatttgtagggcagttaaacgcataaaggactttggattatttatgggtggccttattgctggcacacaataaaaatccgaaagactttgaatctttcggatttttatgatatggcggagaaggagggatttgaaccctcgcgccagtcaccccagcctactcccttagcagtggaacaaaaaatggctaaatacctgcaaaacaatgatatctgtacgttatttgtacgtcattcgatcttatttactgcatccagcgcggcgcagctatccggaatcgtcgactgcacgatcaaacatcgatcgaagctacagccatgtagcaccttcg

SEQ ID NO: 2288 - DNA, 966 bp, unidentified
  source 1..966: mol_type = unassigned DNA; note = Bacteriophage uvig_249187 from the Index of /pub/databases/metagenomics/genome_sets/gut_phage_database (ebi.ac.uk)
aagaaaaaacgcaaggtggagggagctgataagcgcaccgccgatggttccgagttcgaaagccccaagaagaagaggaaagtctagttctgcagagggtgatgccattcgacgaacttgtttattgcagcttataatggttacaaataaagcaatagcatcacaaatttcacaaataaagcatttttttcactgcattctagttgtggtttgtccaaactcatcaatgtatcttagtaccgcattcatttcagtgagagcttactcatcagagttcgctaattcatcatattacaaattaattctttttatttcaatcatagattttgatttgacatttagacaattatatatcaaaatatataaaacagctcccacgctaccaacgtgagagctgtcaaaaggctatacaagctattgcttatacaatatgccccaaccaagcatattgtaccataaagcacctagtttgtataggtgttatttttatactcttttacacatatttttaacaggaaggtgatttttatggaattatatgcacaatatttaaggaaatctagggctgatatggaagcgacgtccgtatcagactaacgcttatccatgtggtcacgaagatgactttaaactgaccatttatcctattatctcaaaataagtttgtttaccgatataaacgtgggtttgatgaacttaatcacctagaaattaaacccacgtttatatcggtaatattatcctccatataatggaaaaactatataaacaaaggaacaccattttctttataataaacatcttcgtggtctacatacttatatgttgtagctttatcgttttcagtaacttccaataagccttttgtttctatccccttttcttttaagtgcttgtcatcaacctgtggaatcgtcgactgcacgatcaaacatcgatcgaagctgtcggagcaggttatcttcg

SEQ ID NO: 2289 - DNA, 966 bp, unidentified
  source 1..966: mol_type = unassigned DNA; note = Bacteriophage uvig_199462 from the Index of /pub/databases/metagenomics/genome_sets/gut_phage_database (ebi.ac.uk)
aagaaaaaacgcaaggtggagggagctgataagcgcaccgccgatggttccgagttcgaaagccccaagaagaagaggaaagtctagttctgcagagggtgatgccattcgacgaacttgtttattgcagcttataatggttacaaataaagcaatagcatcacaaatttcacaaataaagcatttttttcactgcattctagttgtggtttgtccaaactcatcaatgtatcttagtaccgcattcatttcagtgagagcttactcatcagagttcgtgtgctaccggaagcaaagctccgatatgtcgctgcacatcgattttttatgactttatatgtacaagtacgatatagtgtcaagctgcaataccccgttcggatcaaaacacccaacgccagaacggcgaagtatattatttcacagcttggcggcccagacggagagttggctgcttcgctacggtatatgcaccagcgatacacggcaaaacctgacaaagtaaaaggagttttgacagatattgccacagaagaactagcccatgtcgagatgatttccgcgatcctgtaccagctgacgtccgtatcagactaacgcttatccataaaatgcggacgtggacgcagaaacggaggagctgattttgaagacacacataagcagcttaaaaaccgcggcagaatcgctaaaattcagcgattgggaaggcgaatcagacctctctaagctgatcgacgacaggaacagctttgctgaagatttcggagtttctaacagatcatactaaaaaagcgtaaaatatcacacaaaaaacgccctgcggtttcccgcggggtgttgatatatcggaaaggaatggtacttttggacacatactgcatatatctacgaaaatcccgtgccgaggaatcgtcgactgcacgatcaaacatcgatcgaagctgattaaggtgcaactcttcg

SEQ ID NO: 2290 - DNA, 966 bp, unidentified
  source 1..966: mol_type = unassigned DNA; note = Bacteriophage uvig_104410 from the Index of /pub/databases/metagenomics/genome_sets/gut_phage_database (ebi.ac.uk)
aagaaaaaacgcaaggtggagggagctgataagcgcaccgccgatggttccgagttcgaaagccccaagaagaagaggaaagtctagttctgcagagggtgatgccattcgacgaacttgtttattgcagcttataatggttacaaataaagcaatagcatcacaaatttcacaaataaagcatttttttcactgcattctagttgtggtttgtccaaactcatcaatgtatcttagtaccgcattcatttcagtgagagcttactcatcagagttcgagaaatacagaggatatattcagagaatttacatcttcaaaagacgtgatttaggaggttttgatatgataggatttgtaattggactgcttgtaggcggtacagcaggagtattcacaatgtgtctctgcacaacggcaaagcaggcagatgaaaatatgtcaaattcggacaagtaattttgtccggtttggtaataccattctgaaaagatttgtggtattcttgttggtaaaacggaggtgagaaaatgccgacagtaacggttatacagccgacaatagcagaagaaaaagcagtgacgtccgtatcagactaacgcttatccatatgagctggagtttcatttgatcggcggattgaaattcaaagaaaacatataacagaaaatgccttgcagtaaaattgcagggcatatttttgttggttttggtactggatttccacagaattttgtagtattgttgtacacggaggtgaaattagatggcaagaaacagagtaatcccgttcggctactgcatgaaaaacggcgaaataacgaccgaaccaaaagaagtttatgcagttgcagagattttcagagaatatctgaatggcagcagtttacttcaaattgcaaagcttatgggaatcgtcgactgcacgatcaaacatcgatcgaagctgtatgacacgatgctcttcg

SEQ ID NO: 2291 - DNA, 966 bp, unidentified
  source 1..966: mol_type = unassigned DNA; note = Bacteriophage uvig_324974 from the Index of /pub/databases/metagenomics/genome_sets/gut_phage_database (ebi.ac.uk)
aagaaaaaacgcaaggtggagggagctgataagcgcaccgccgatggttccgagttcgaaagccccaagaagaagaggaaagtctagttctgcagagggtgatgccattcgacgaacttgtttattgcagcttataatggttacaaataaagcaatagcatcacaaatttcacaaataaagcatttttttcactgcattctagttgtggtttgtccaaactcatcaatgtatcttagtaccgcattcatttcagtgagagcttactcatcagagttcgattttcttgctcaattatcttaacatcaatataagaatcaaaattatccctttcacttaacactctcttaatggttttacatagtttttctaaatctacttcctgattcataaactcacctattatttacttagttaagaatatgctaaaatataaggatattgacaatatttaagaccttttatacttttccttcttatcattagatgagctactttctgcataagatatttagaagggatgatgtcttatgttaaggtgtgctatctatatcagagtatctacagaagaacaaaaaatgacgtccgtatcagactaacgcttatccatttgattgtattactgtagatagtcagaatagaatccaaatattctatcgataattttttatttacattaatatatccccttgaatattaactttaagtctagtatttttcactaattatgttacaatagatagcaacaaaaacatcgaaatcttttttaaataacattgtattatctccacttccactgtcgcagtcttcggaacaattataacactatataccaatttcaactccacggagcaagataaatacaaactcatctatacactgggtggtactaaaaaagatgttttatttaggaatcgtcgactgcacgatcaaacatcgatcgaagctctcgcatgcatcggagaatg

SEQ ID NO: 2292 - DNA, 966 bp, unidentified
  source 1..966: mol_type = unassigned DNA; note = Bacteriophage uvig_214087 from the Index of /pub/databases/metagenomics/genome_sets/gut_phage_database (ebi.ac.uk)
aagaaaaaacgcaaggtggagggagctgataagcgcaccgccgatggttccgagttcgaaagccccaagaagaagaggaaagtctagttctgcagagggtgatgccattcgacgaacttgtttattgcagcttataatggttacaaataaagcaatagcatcacaaatttcacaaataaagcatttttttcactgcattctagttgtggtttgtccaaactcatcaatgtatcttagtaccgcattcatttcagtgagagcttactcatcagagttcgtttacgatttaattgaagattctattaaataaattcacaagataaaatagtaaaagtacatgcaatagtggttgttgcaaattacgcaacaactaaaaaaagtcccgtgccctgctggaacaggtacacgggacgcgccgtcggtattggcgtaccgtatcggcaatttgtaaatctactgtgcgaggctgatttactctattattataccataaatcagtctcctatatagggaaggactgatttttttatgttaaaaaccgatatgacaaacgaaaaaagtacagcagttatctacgcgacgtccgtatcagactaacgcttatccattgatgacgggaaatcccgggtgttcgcgttgcgaacgtttggtgacccggtagggattcgaaccctagacctactgattcgtagtcagtcactcggggcataaagtagattcatgcaataccgatttacacaaactattttacactccccattttgaatttttctttgtcataccatacgaaaaattcaccgttatttactttttcatcgcgttcgtccgggtcgtactgatcacaatcaacgacttcactcagcggcgcgtatgtcgctgaaatggtcatcggcgtaccacaaatcagaggaatcgtcgactgcacgatcaaacatcgatcgaagcttggtcgagtacacaggaatg

SEQ ID NO: 2293 - DNA, 966 bp, unidentified
  source 1..966: mol_type = unassigned DNA; note = Bacteriophage uvig_13945 from the Index of /pub/databases/metagenomics/genome_sets/gut_phage_database (ebi.ac.uk)
aagaaaaaacgcaaggtggagggagctgataagcgcaccgccgatggttccgagttcgaaagccccaagaagaagaggaaagtctagttctgcagagggtgatgccattcgacgaacttgtttattgcagcttataatggttacaaataaagcaatagcatcacaaatttcacaaataaagcatttttttcactgcattctagttgtggtttgtccaaactcatcaatgtatcttagtaccgcattcatttcagtgagagcttactcatcagagttcgttcaaattaactcacaaaaggaggaatccgaatgaatccaaacgcagattatctcggcatcgtcaccatgcttcgcagcctgcgggagcagggtctcgtcagcggcagcgaagccaaaaaaatcgccgcgcggctgagggtacagcttggcgcagacatcattatttctctttgatttcttcgcttttaggatagctattgcggatgttatatggtattgtgtgttactgacgaaggaggtggcagaggaatgagtgataaggagaaaaccaacggttctctggcgatggctccgcgggtgacgtccgtatcagactaacgcttatccatgtcttctcaatggactggaggtcacagaaaaaatagaaaggacacggagataatgggaaaacgaaagcagcccttcggctataaaatgaagctcggcgagatcgtgccgcagccgcaggaggcggaaacggtgcggagcatctacctgcaataccttgctggtgtctccttcaagcagcttgccgaacagcttcagacagaggatgttccctacgatgaggacaagtcctggaacaaaaatatggtggcgcgaattctggaggatgaccggtatatcggtgagaaagaattcccggcgctggaatcgtcgactgcacgatcaaacatcgatcgaagctccgtcgtcctctatgcgaca

SEQ ID NO: 2294 - DNA, 966 bp, unidentified
  source 1..966: mol_type = unassigned DNA; note = Bacteriophage uvig_11401 from the Index of /pub/databases/metagenomics/genome_sets/gut_phage_database (ebi.ac.uk)
aagaaaaaacgcaaggtggagggagctgataagcgcaccgccgatggttccgagttcgaaagccccaagaagaagaggaaagtctagttctgcagagggtgatgccattcgacgaacttgtttattgcagcttataatggttacaaataaagcaatagcatcacaaatttcacaaataaagcatttttttcactgcattctagttgtggtttgtccaaactcatcaatgtatcttagtaccgcattcatttcagtgagagcttactcatcagagttcggatgatggaaggtggagcgaatgaggtgcggtataagattgctgaatttctcttaaaaaggatgcatgaagataagctgttaaccgaggaagaatgggaaaaaatccgggttttgaatgtcaagaccttttcccccgaactggcaaaagtatatctgtaataacactggatatataagggactatgtggtagtgtatgttgctgacagggagtgcaaccccttgaaaatactaggaaaggagaaaaaagcatggcaaaaaaagtaactgtcataaaggcagcaaaagagcagaaacatacgacgtccgtatcagactaacgcttatccatataaacttggctggtgtgagtttccgtataaatcaagggtaataccaacctgagaacccttaaaaacccttaaagtcccttacatggcgagaaatcccatgaaatggggcttttttaggcttaaaaggtaggaaatgcctttaaaaaatacggaatttgtaaatgccaacttgaaaagagaaagaggagtttaaaaggcgtaaatgtcagagatgatattggtaaaaagtatgggttttaaatcgttcaaaaaccgtttaaaagtagtttgagaaagtgcttgaaagtattgattttgttggaatcgtcgactgcacgatcaaacatcgatcgaagctatagacgatacgtctgtgta

SEQ ID NO: 2295 - DNA, 966 bp, unidentified
  source 1..966: mol_type = unassigned DNA; note = Bacteriophage uvig_81430 from the Index of /pub/databases/metagenomics/genome_sets/gut_phage_database (ebi.ac.uk)
aagaaaaaacgcaaggtggagggagctgataagcgcaccgccgatggttccgagttcgaaagccccaagaagaagaggaaagtctagttctgcagagggtgatgccattcgacgaacttgtttattgcagcttataatggttacaaataaagcaatagcatcacaaatttcacaaataaagcatttttttcactgcattctagttgtggtttgtccaaactcatcaatgtatcttagtaccgcattcatttcagtgagagcttactcatcagagttcggtgcaggagacaactgtaaaatccatatacgaaaacggaattgcagcaggacagtggctggatgacttgcgtgaaaatatggagatagaaaagctggaccgtatgcttttggtttctctgattgacaagatcttagtctatgaggacaagacggtagagatagtgtttaagtaccgtaatgagatggcaaaggcggtagagcttgtaaagggtgaactggaagcggaagccatgagggaggtgtcctaggatggcaagaaaagaaggaagatttaatgcacttgcggataaggttccttcgacgtccgtatcagactaacgcttatccattccgttttccgagaagaaccaagtggaatgaaggaggtaggacagatgtctaatctggttatgtatttaagattatctttggaggatgatgtgaatgcggatgagagtaacagtattaccaatcagcgtagaatcatccgtgattatataagctcacatgaagatttgcgttccatgactgtaacggaaaagtgtgatgacggatattccggcacaaacatgaaccgtccgggaatgcaggagcttcttgctatggtaaaagagcagagggtggactgtatcattgtaaaggatatgtccggaatcgtcgactgcacgatcaaacatcgatcgaagctgtcgccgtatggactcctta

SEQ ID NO: 2296 - DNA, 966 bp, unidentified
  source 1..966: mol_type = unassigned DNA; note = Bacteriophage uvig_250870 from the Index of /pub/databases/metagenomics/genome_sets/gut_phage_database (ebi.ac.uk)
aagaaaaaacgcaaggtggagggagctgataagcgcaccgccgatggttccgagttcgaaagccccaagaagaagaggaaagtctagttctgcagagggtgatgccattcgacgaacttgtttattgcagcttataatggttacaaataaagcaatagcatcacaaatttcacaaataaagcatttttttcactgcattctagttgtggtttgtccaaactcatcaatgtatcttagtaccgcattcatttcagtgagagcttactcatcagagttcgttgccgatcatgttccttctcgtaggatgacaaaagaagctatgcagaaggattttgactatgagatggcacagaagataacgaaaaatctaattgatgaggggctgatttccagtgacgaatacgacagaatatcggcattaaatgctcagaaattctctccgttttatggggatttgatggatatataacttgataattacacccttcagagtgatatatagtactgccaaaacaaggaggtgagacaatggcaaggataaccaagattgaggccacaaagagtttcatagaaaaaaagacgtccgtatcagactaacgcttatccatccttcaatctgaagtgcggactgaatataacggaaaggttggtggtggtgtgacacatactccatacggttacattattgaagacgggcaagcggtcattgatgaaccaaatgcagaaagagtgagaatgttattccgagaatacattgaatgtggctccataagagcggcaggcaagaaagtcggaattgaaaaaacgcactcggtaattggcagatttctaaaaaacaaagtgtatgttggaaccgagtattatccacagatcgtagatgtggatacttttgcaaaggcacaggaaatggaatcgtcgactgcacgatcaaacatcgatcgaagctcagtgcaagttatgagtaag

SEQ ID NO: 2297 - DNA, 966 bp, unidentified
  source 1..966: mol_type = unassigned DNA; note = Bacteriophage uvig_590864 from the Index of /pub/databases/metagenomics/genome_sets/gut_phage_database (ebi.ac.uk)
aagaaaaaacgcaaggtggagggagctgataagcgcaccgccgatggttccgagttcgaaagccccaagaagaagaggaaagtctagttctgcagagggtgatgccattcgacgaacttgtttattgcagcttataatggttacaaataaagcaatagcatcacaaatttcacaaataaagcatttttttcactgcattctagttgtggtttgtccaaactcatcaatgtatcttagtaccgcattcatttcagtgagagcttactcatcagagttcgtaagctataaaagaacaagagtaacgatagcagatgagcagcacaataattaaaatgatctgtatgtgttctcgtttaaatatgatagaccacttacagacaaaataaggctacaaaaatcccaaactgtgttgtcgaactgtgctgtcgaatcttgtcgaacgattctgcttgcaattatcgacagagtatgctattttataactgtacaaaagagaacaagccatgcccgctaaacaaggctaaaacgtactaaggagagagctgtccgaaaggatggctcttttattttgcaaaaaagacgtccgtatcagactaacgcttatccatatatgacgaaaaatgtgttagaaaagttacgagagcaaattgccccacaaactaaggtcgaaagaaaaaaggagctattttttatattcgatacgttaaaaacaactggaaaaataacagaagaagactatgaaagttgtattgaagcaattcgcctgaaatataaataaacagatacaaacccacttaatggtatcatttcctgcaaagatatgttataattaagtgggatttttgtgaatggaggagtatgtatagtagcaagcgagcagttatttactgccgagtcagtaccgaggaggaatcgtcgactgcacgatcaaacatcgatcgaagctattactggttacgaacagga

SEQ ID NO: 2298 - DNA, 966 bp, unidentified
  source 1..966: mol_type = unassigned DNA; note = Bacteriophage uvig_135439 from the Index of /pub/databases/metagenomics/genome_sets/gut_phage_database (ebi.ac.uk)
aagaaaaaacgcaaggtggagggagctgataagcgcaccgccgatggttccgagttcgaaagccccaagaagaagaggaaagtctagttctgcagagggtgatgccattcgacgaacttgtttattgcagcttataatggttacaaataaagcaatagcatcacaaatttcacaaataaagcatttttttcactgcattctagttgtggtttgtccaaactcatcaatgtatcttagtaccgcattcatttcagtgagagcttactcatcagagttcgaggtggggaaacggatctgagcgtaagagtagactcttagcagaggggtatgattacggtgcggttcagaagcgagtaaacgaaatgttattataagtttgggcctgggaggagtaatccttccgggttctttttttgtattttaccagttcggtcataccgataattatacccttgaaaccgctaaattgcttgacttatagcggaacaagagcgttaataggactaccaaaaaggaaggagaattcgcatgaaacttagaaaaatagaacctttaaaacctaagcaaaaaaagcttaggacgtccgtatcagactaacgcttatccatgcagcgtactgccgcgtgtcaacggaccaagaagaacagttatcaagttatgagaatcaggtgagatactatacggaaatcataacaagaaatcctgattatgagttagcagatatttatgcggatgaaggtatctccggtaccaacaccaaaaagcgtgatgattttaataggatgattgaggattgcaggggtgggaagatagacctcattattacaaagttgatttccagatttgcaagaaatacactggattgcctgaattatgtaagagagctgaaggaccttggaattggtattggaatcgtcgactgcacgatcaaacatcgatcgaagctgttacgcgtgtgaaccagga

SEQ ID NO: 2299 - DNA, 966 bp, unidentified
  source 1..966: mol_type = unassigned DNA; note = Bacteriophage uvig_166254 from the Index of /pub/databases/metagenomics/genome_sets/gut_phage_database (ebi.ac.uk)
aagaaaaaacgcaaggtggagggagctgataagcgcaccgccgatggttccgagttcgaaagccccaagaagaagaggaaagtctagttctgcagagggtgatgccattcgacgaacttgtttattgcagcttataatggttacaaataaagcaatagcatcacaaatttcacaaataaagcatttttttcactgcattctagttgtggtttgtccaaactcatcaatgtatcttagtaccgcattcatttcagtgagagcttactcatcagagttcgtaaaaaaggaactaaaacggtatttatgtctataaaactacaatatctcattaatgaatactgtatagaaaacgacacaaaaataggtgacataacagaaacggcaatagtagaattcttattacgtcacgactataccggcaaactgaatacaattatgcttactcctttatcggagggggacgaggggaacacctctcaaagtgaggtttaatcagcaatatcgcaaatttacagagggggaatttatatgggtatccccctcttatcaggaggaatatacatggacaatagattaaagacgtccgtatcagactaacgcttatccatatttaaaggaacggtggtttagaacaaccattctgacattagacagatattaaaatataccgtattttctatatgagaaaatacggtatatttttttgcacaggcattttcactcccccttgttcaaaaattacttttttgaaaagtttttaatgaacaatatattattacaagtttttttgtaataatatttcaaagaatggagggctataaaatgcctaatattttaaataataatgttgtctatgatgacaatactaaacagctgttatatcaatcagaagatgaaaacggcaatacggaatcgtcgactgcacgatcaaacatcgatcgaagctcggcgtgtgttctgtcatga

SEQ ID NO: 2300 - DNA, 966 bp, unidentified
  source 1..966: mol_type = unassigned DNA; note = Bacteriophage uvig_422831 from the Index of /pub/databases/metagenomics/genome_sets/gut_phage_database (ebi.ac.uk)
aagaaaaaacgcaaggtggagggagctgataagcgcaccgccgatggttccgagttcgaaagccccaagaagaagaggaaagtctagttctgcagagggtgatgccattcgacgaacttgtttattgcagcttataatggttacaaataaagcaatagcatcacaaatttcacaaataaagcatttttttcactgcattctagttgtggtttgtccaaactcatcaatgtatcttagtaccgcattcatttcagtgagagcttactcatcagagttcgaacaaagacattaaagcaatatacaagtgatggttcatctgaatttgtcgaagatgaatattacaatacagatttaagaactgcacaaaaggatagtcttgcttacctaataggtaattacatattctataaatcttatggaatgtatttttcaaaggaattacaagaccaatatggaaatcgtgatgtactaaagaaataaaaaaagagccacctacacaggtggctttattcatagaaaggattaactatggaattgtcaaaaggagttatatatgcacgttactcgtcagataagcagacgtccgtatcagactaacgcttatccatacttttatattgcacgatcaaggtacccgatacgattagttattacatattagatttattcttcatcaacacgatatgacattcttaaatgacttaacaattcatttacagtttcttcattaaatgttttaggctcaacaataggcccatcgccatattctgttatgtaaatatattgcattttatctgttggtttaaaatcagggtattcatcccttaaatcttcaaaatcatcactcaaccaatcttctaaagtatattcaccaacgcaaggcgaacctttaaaatcatgtgtaacaaggaatcgtcgactgcacgatcaaacatcgatcgaagctgacaagacctatgtcactag

SEQ ID NO: 2301 - DNA, 966 bp, unidentified
  source 1..966: mol_type = unassigned DNA; note = Bacteriophage ivig_3102 from the Index of /pub/databases/metagenomics/genome_sets/gut_phage_database (ebi.ac.uk)
aagaaaaaacgcaaggtggagggagctgataagcgcaccgccgatggttccgagttcgaaagccccaagaagaagaggaaagtctagttctgcagagggtgatgccattcgacgaacttgtttattgcagcttataatggttacaaataaagcaatagcatcacaaatttcacaaataaagcatttttttcactgcattctagttgtggtttgtccaaactcatcaatgtatcttagtaccgcattcatttcagtgagagcttactcatcagagttcgttagaaaggattcagagatacaaggaattcggattacggttagaagttgtgtgtacaccagaaagggctagtatgtggaaaggatgtgtgattcatgaaatatgagtcgctttttttagcttaataatggacaaaccttgatgcatagcatatataaagaggtgatgctaggtgcatgtcacaagaaacaagattcctgatgacaagcaaatttttaagtgctatgattatttacgagaggtgataaataatgatagcgctctacgggagagtctcaacagaagaacaagcgaccaaagggacgtccgtatcagactaacgcttatccattaaaggaagttatcgtagaagggaaagagaaaataaacattaactacttctagctaggtaatgacataagtatttcgttttcaatacaacgagctgcataagttgcaagttttgttcctttatcagtggaataactttcaactcctttaatcaaaccaattgtgccaattgaaataaggtcttctgcatcttctcctgtattttcaaactttttaacaatatgtgccactaatcggagattatgttcgattagtttatttcttgctgtttcacttccgtcctgcatttgtttaatatattggaatcgtcgactgcacgatcaaacatcgatcgaagctcttggtgccttgtatgaagg

SEQ ID NO: 2302 - DNA, 966 bp, unidentified
  source 1..966: mol_type = unassigned DNA; note = Bacteriophage uvig_404379 from the Index of /pub/databases/metagenomics/genome_sets/gut_phage_database (ebi.ac.uk)
aagaaaaaacgcaaggtggagggagctgataagcgcaccgccgatggttccgagttcgaaagccccaagaagaagaggaaagtctagttctgcagagggtgatgccattcgacgaacttgtttattgcagcttataatggttacaaataaagcaatagcatcacaaatttcacaaataaagcatttttttcactgcattctagttgtggtttgtccaaactcatcaatgtatcttagtaccgcattcatttcagtgagagcttactcatcagagttcgacgaaaaccccgccgaatatcttacgttgactatctatcccattgtggattaattttttgcagagaatagagacaaccttgtggtcgcgattcatcgcgaccacaaggctcccactattattttgctacttccagccatcgatcatcgccttaacctcggcggtcttggcgatgaggtcgttgtggatggcttcccacgcggcgatcatgccgtcggcgtaggcgggcttttgcttgtactcctcggaggccttgtagccctcgatcagcttcttcaccacggcgtggccgttggtgttggacgtccgtatcagactaacgcttatccattgacgagctgaaggacggccttgcggcggcttacaataagctgcgccacgatctcggttatcgcggcgacgcgtttgccgcggaggacgtctccatcagcgacgacctcggccccgatgaccgcatcgcctggccgaatacgcactatgtctgcatccgccggatgggcgacgacgactttgtggcaaggttcggatcgccgcaggccatcgggttctgtgcgtttttcgagggaaaggaggaataacccatgatctgcgccatgtatctgcgcaagtcccgcgcggactatgaggccgaggaatcgtcgactgcacgatcaaacatcgatcgaagctgtcctccgcagataaggagg

SEQ ID NO: 2303 - DNA, 966 bp, unidentified
  source 1..966: mol_type = unassigned DNA; note = Bacteriophage uvig_554169 from the Index of /pub/databases/metagenomics/genome_sets/gut_phage_database (ebi.ac.uk)
aagaaaaaacgcaaggtggagggagctgataagcgcaccgccgatggttccgagttcgaaagccccaagaagaagaggaaagtctagttctgcagagggtgatgccattcgacgaacttgtttattgcagcttataatggttacaaataaagcaatagcatcacaaatttcacaaataaagcatttttttcactgcattctagttgtggtttgtccaaactcatcaatgtatcttagtaccgcattcatttcagtgagagcttactcatcagagttcgtgttaaaaaaactttgactattccggagtggctaaatgaagaagcaacagcattgggagttaatttttctcaggtattgcaggaagcattaatagctaaaatcgaagctaaagtctaaataataaaaatcccctgtgcaaccaacacaggggaaagaaaggttatgcggtatatgaatactacgaacaacttaagtatatcatatgaccgcttatttttctatatattttaaaataaaggaggtctttgtatgccccaaaaaacactagtattcggatatgttcgtgtttcgactgaaaagacgtccgtatcagactaacgcttatccattacaagctgtcaacgtggacggtcagcaagtatcggttgtttggaggatttgattttacaaaattatacgcactatgcacatagtatatataattttgtatttacaaataaaaaattggggagtggttgcaattgccactcccaataaattaatattctgcaaaagcgtcttgtatcgcttcgtatatgtgaacaggatcgagtttaaattttgtaaatctgtcaactatactttttacaaaatagtaatctgttgaaacgtcttctataagcttaaccccttccttacagaagacttttggaatcgtcgactgcacgatcaaacatcgatcgaagcttcaccggtaaggtcaactgg

SEQ ID NO: 2304 - DNA, 966 bp, unidentified
  source 1..966: mol_type = unassigned DNA; note = Bacteriophage uvig_173267 from the Index of /pub/databases/metagenomics/genome_sets/gut_phage_database (ebi.ac.uk)
aagaaaaaacgcaaggtggagggagctgataagcgcaccgccgatggttccgagttcgaaagccccaagaagaagaggaaagtctagttctgcagagggtgatgccattcgacgaacttgtttattgcagcttataatggttacaaataaagcaatagcatcacaaatttcacaaataaagcatttttttcactgcattctagttgtggtttgtccaaactcatcaatgtatcttagtaccgcattcatttcagtgagagcttactcatcagagttcgaagaattctgtcggaaaggcattaacgataatcggaattcttgtaataatactgggaacaatcagtagtttttcaatgtccttttatgaggtacatgggagtcctgagttttcatttacgaattttatcattccagaagcattcagccttgtaagtggaatcatgtttcttggttttggtgaaataattaagcttcttcaggatatatgcaataagatcaaatgattgtatgagttgaaacgaggttattatggctgctattgactttaataatgttgtagatctgtatattcgtgtcaggacgtccgtatcagactaacgcttatccatataaagttgtagtcctcaatacagatgtcaccatttactggtctttctgctgatcatcctttaataccagcctgcagatagtttctacatttgcggtccaggggaactggtccacagcgcaggctttctctaccacatagccgccagccaggaaaacttccaagtctcttaccagactggtcggtttgcatgaaatgtaaatgatagttttacacctaatagtggcaatgatcttaacgaatgcttctattaggtgaatatcgaaaggagttttacatgcctaaaacaaaaatacaccatggaatcgtcgactgcacgatcaaacatcgatcgaagcttaatatacacgtctctctgg

SEQ ID NO: 2305 - DNA, 966 bp, unidentified
  source 1..966: mol_type = unassigned DNA; note = Bacteriophage uvig_110260 from the Index of /pub/databases/metagenomics/genome_sets/gut_phage_database (ebi.ac.uk)
aagaaaaaacgcaaggtggagggagctgataagcgcaccgccgatggttccgagttcgaaagccccaagaagaagaggaaagtctagttctgcagagggtgatgccattcgacgaacttgtttattgcagcttataatggttacaaataaagcaatagcatcacaaatttcacaaataaagcatttttttcactgcattctagttgtggtttgtccaaactcatcaatgtatcttagtaccgcattcatttcagtgagagcttactcatcagagttcgcacccacttgaaaggcaagtgcgacaacaattcgagcaattcatagaagaatatcgctcaaaaatgtaatcaataaaaaaccgctcccaccgacggcaatcggcgagagcggaaaccattacaacgggtgcaatgatacatttcaaatgcaaaaatattgtatcatacccttgtaaatttttcaagtgaagtttacaagggatttttgcacccttttttagaatataaatattaaaaaaggagtgtttttatgaaaaaagttgcgtgttatgtaagagtttcaacagaaaatcagattgagacgtccgtatcagactaacgcttatccatttgatgaggaatctgtaaatataacttggagaattgaaagcaaaattgtatagtctatgttaatgggatttgggtgtaatgcttgtggtgtcactggttgtcgaattatcgaatctccaagggaacgaattatagctaccgtaacaaataattttgttccctgtaacggaagatttccaactttaattgcaataataactatgtttttcgccacagggatttcattaccatttcgttcgcttgtttcggcgggcttattattgacggtaatagtttttggagtggtagtcacactcttagggaatcgtcgactgcacgatcaaacatcgatcgaagctgcttctcaagtaatctcgcg

SEQ ID NO: 2306 - DNA, 966 bp, unidentified
  source 1..966: mol_type = unassigned DNA; note = Bacteriophage ivig_1400 from the Index of /pub/databases/metagenomics/genome_sets/gut_phage_database (ebi.ac.uk)
aagaaaaaacgcaaggtggagggagctgataagcgcaccgccgatggttccgagttcgaaagccccaagaagaagaggaaagtctagttctgcagagggtgatgccattcgacgaacttgtttattgcagcttataatggttacaaataaagcaatagcatcacaaatttcacaaataaagcatttttttcactgcattctagttgtggtttgtccaaactcatcaatgtatcttagtaccgcattcatttcagtgagagcttactcatcagagttcgttatggtatgtctaaaaaacaaatcaaagaatcattgcttagcgaagaggatggcggaggttttacaaaatcagaagtcaactacgctattaaacatttagaagacgaagattaaaataaaaaaagcccacgctcaaattttggacgaggagagcgtgagctaggaagtatacaagaaaaagccattaaatgggcgtttttcttgtacccattttatcatttttcaacgataattgaaagaggtacaaatatgaacaaagtagctatctatgtacgtgtatcaaccactaaccaagccgagacgtccgtatcagactaacgcttatccatttaacaaagttcaagtgactgctgacagtatcaaaattttatggaaaatttaacaaatttagtatcattcatttccacaagtgtaaaagcttctacagacttttaagaccagactgataatcgttgctaataaagcaagagctaccaagccctcaaggagtatgtaagcttttagtttctgtttttttatagttaccacttcctatgtacaattgataatcgattgcctggttttctgtatgaaactgtatcttggtaagagatgaattaccccctgatttatcaaaaacaagctgatacggaatcgtcgactgcacgatcaaacatcgatcgaagcttgaccgacaggcacacatcg

SEQ ID NO: 2307 - DNA, 966 bp, unidentified
  source 1..966: mol_type = unassigned DNA; note = Bacteriophage uvig_144279 from the Index of /pub/databases/metagenomics/genome_sets/gut_phage_database (ebi.ac.uk)
aagaaaaaacgcaaggtggagggagctgataagcgcaccgccgatggttccgagttcgaaagccccaagaagaagaggaaagtctagttctgcagagggtgatgccattcgacgaacttgtttattgcagcttataatggttacaaataaagcaatagcatcacaaatttcacaaataaagcatttttttcactgcattctagttgtggtttgtccaaactcatcaatgtatcttagtaccgcattcatttcagtgagagcttactcatcagagttcgttggaagatatatccaaaatgagttccgtctggatatctttcttcgtctgtaatcactatctccatcttccgtgtgcgaatgaactttcacacctcgaaatctatacaggtaaatccacgttgctacaaatgtggggtcacttcatattgtcctaactgaatcgaaactccagctccaatattccatggagcagaggctcctttgtcgtattatcgtttagcacattctggacaacatccgtcaacatccatgaaaagttttctgtatgctccagcttcctgctgatccgttttacatctgacgtccgtatcagactaacgcttatccattttcacaggaagtttcttccggcatttatgaagatctgtccataacaatatcagatcttctccgataaaaataaaaccggctcctgcgtcaacaggaaccggcaaggaatatatccgaagatgataccccaaaattaagcaaacatattgtatcatcttcggacagcccccgcaagcggaacatccgttccccgctggctgttatttttatacccttttttacatacatttgatacaggaggatgatactatgcaggaaatgaacatctctatcaatgatctgatcatgtatctgagaaaggaatcgtcgactgcacgatcaaacatcgatcgaagctgtcttggatcaggaccagga

SEQ ID NO: 2308 - DNA, 966 bp, unidentified
  source 1..966: mol_type = unassigned DNA; note = Bacteriophage uvig_193710 from the Index of /pub/databases/metagenomics/genome_sets/gut_phage_database (ebi.ac.uk)
aagaaaaaacgcaaggtggagggagctgataagcgcaccgccgatggttccgagttcgaaagccccaagaagaagaggaaagtctagttctgcagagggtgatgccattcgacgaacttgtttattgcagcttataatggttacaaataaagcaatagcatcacaaatttcacaaataaagcatttttttcactgcattctagttgtggtttgtccaaactcatcaatgtatcttagtaccgcattcatttcagtgagagcttactcatcagagttcgcggtgaggtttaagggcgggtttgaaatcagaaaggacttaaatggaaattgaaatcccaacatggctttatgaaatgcttctgatcgaagcggcagaaactggttccgcgatagaagatatcgcggaattttgctttagggcaacaccgcataatcgcccccaaaaacgggacacagtttcaaacattcggtaaatgccagtgtatctcttaaaatgtccgccaaggcgcactgaatcaagccgtcagacaaggtctgtcagccaggatcaggtttgccaaagcaaacattatattcaagacgtccgtatcagactaacgcttatccataccgaaaatatgtcggcgagaacggttatccgcagattataacttcagaggacttccggctggcggctctgataaaggcagaacggaatacataccgcaaacccgctccgcagaatgagccgcggcagcaggaaacagtgttcacagaatatgagccgactgacgagattcagcgcatgactaatgaaatcaatcggttaatcaattcggaagatactgataaggaaaaggttgaagcacttatagtaagatgcgctcaattgaaatatgcgacaataagtgtggtgagaagatgatgcaggaatcgtcgactgcacgatcaaacatcgatcgaagctcgacggtatcggcctcaaca

SEQ ID NO: 2309 - DNA, 966 bp, unidentified
  source 1..966: mol_type = unassigned DNA; note = Bacteriophage uvig_256500 from the Index of /pub/databases/metagenomics/genome_sets/gut_phage_database (ebi.ac.uk)
aagaaaaaacgcaaggtggagggagctgataagcgcaccgccgatggttccgagttcgaaagccccaagaagaagaggaaagtctagttctgcagagggtgatgccattcgacgaacttgtttattgcagcttataatggttacaaataaagcaatagcatcacaaatttcacaaataaagcatttttttcactgcattctagttgtggtttgtccaaactcatcaatgtatcttagtaccgcattcatttcagtgagagcttactcatcagagttcgtagtatttgaccgggaaacccggagttttacgttcttttactacacatcataagttattacaatacggcggccccgacggcgagatgggcgcatccatgcgctatctgtcccagcgctacgccatgccttataaagaaggcaaggctgttttgaccgatatcggcacagaggaattggcacatctggaaatgatcgccgccattgtccatcagctgacccggaacctcacagccgagcagctggtagaacagggcttcggaccctattatattgaccatgccaccggaatctggcctcaggacgtccgtatcagactaacgcttatccatatagcaaaatttgaagtttacatcaattacatttttcacaagattaagccacaaatttcattaataatgactataagtaaaaaaccgcccggtgttaccagcaccgaacggcttttacatagattctcttgccggatgcccggaaagataattcagcttgaacacctgaattatatcatttctggtacatcctggcaaggggtgtattttttatacccatttatcgtataatccacaaggagatgatataatgtcacaattatccaccagcaatgcacaacccttggaaatcggggccgcggaatcgtcgactgcacgatcaaacatcgatcgaagctggatctgtccgaaggtggca

SEQ ID NO: 2310 - DNA, 966 bp, unidentified
  source 1..966: mol_type = unassigned DNA; note = Bacteriophage uvig_206777 from the Index of /pub/databases/metagenomics/genome_sets/gut_phage_database (ebi.ac.uk)
aagaaaaaacgcaaggtggagggagctgataagcgcaccgccgatggttccgagttcgaaagccccaagaagaagaggaaagtctagttctgcagagggtgatgccattcgacgaacttgtttattgcagcttataatggttacaaataaagcaatagcatcacaaatttcacaaataaagcatttttttcactgcattctagttgtggtttgtccaaactcatcaatgtatcttagtaccgcattcatttcagtgagagcttactcatcagagttcgacttattataccaaaaaccaacaaatcacgcaaggaggaagcctatggagcaaacgcaacaggaacagttcattatccggcgcatcggcggcaccacctataaggtaagggtcgcattcagcgagacggcagcggagaccatggaggaaaagattctgcggatgatccgcaatgaaggggttacaaatgacggtacttgtggtataatggaggtgccacaaatgagccgtcagtctgaaaggagcgcatcatgagcgtgaaacagactgaggaaaaaatcacggcgttgtatgaacgcctgacgtccgtatcagactaacgcttatccatggatggaagcgcaactggagcaaacagatgctcccacgcaagaaacagcataatgttatgcaaggcggtttgcgagatgcaggccgcctttttgtacacttaaacaacattttgaagtccgcacagcggcagaaaggaaaatatcatgaaaaagactttttattccgtcacctacgcagtatggggatccagcttctgccgtgaggcatggttcgacagcaagtccgcagcggacgccttcgccgcacacgattaccgggacgacccggtggcccacacctacagcaaggcggacagcatggaatcgtcgactgcacgatcaaacatcgatcgaagctattagctcttcgccgagtca

SEQ ID NO: 2311 - DNA, 966 bp, unidentified
  source 1..966: mol_type = unassigned DNA; note = Bacteriophage uvig_158624 from the Index of /pub/databases/metagenomics/genome_sets/gut_phage_database (ebi.ac.uk)
aagaaaaaacgcaaggtggagggagctgataagcgcaccgccgatggttccgagttcgaaagccccaagaagaagaggaaagtctagttctgcagagggtgatgccattcgacgaacttgtttattgcagcttataatggttacaaataaagcaatagcatcacaaatttcacaaataaagcatttttttcactgcattctagttgtggtttgtccaaactcatcaatgtatcttagtaccgcattcatttcagtgagagcttactcatcagagttcgaaattgttttcgaccggcagatgaacgaattccatttctactactatgcgtagatgattaccacagaattccagactgtctcagttgacataatacaccattttttagtaaataacaagatatataaaatgcccggaatcccttgtaaatacaaggttttccaggcattcctataggtttatgcattttgggccgccatactgactcataataaacgtcgccagcttaggattcggtgttgtaatatttaccggatactgtaatctcttttcatatctccacatcagccgcactctccttgacgtccgtatcagactaacgcttatccattggattcccgaatatgagaacaattcatttgatgaagtcaaggtagatttttcagatttatttgaataaatagatgaaaaaagccccaggagctaccaactcccagagcctttcacatagattctcttgccggatcattccggaaagatatatcattctcgcaaattgattatatcatttctggtacgtcctggcaaggggcgtattttttatacccaaaattaatacacttaaccaaggagatgatatcatgaccacccagtccaccgtggaaataggcgctgcctatatccgcgtcagggaatcgtcgactgcacgatcaaacatcgatcgaagctatgaccgacaggccgactca

SEQ ID NO: 2312 - DNA, 966 bp, unidentified
  source 1..966: mol_type = unassigned DNA; note = Bacteriophage uvig_46185 from the Index of /pub/databases/metagenomics/genome_sets/gut_phage_database (ebi.ac.uk)
aagaaaaaacgcaaggtggagggagctgataagcgcaccgccgatggttccgagttcgaaagccccaagaagaagaggaaagtctagttctgcagagggtgatgccattcgacgaacttgtttattgcagcttataatggttacaaataaagcaatagcatcacaaatttcacaaataaagcatttttttcactgcattctagttgtggtttgtccaaactcatcaatgtatcttagtaccgcattcatttcagtgagagcttactcatcagagttcgcaaaaatggaggtctacatgagccatgttcaatctcttaccacggataatactggcgcatcgtctattttcgataagtgcgccgaaaaaatactgtggctaacgtattttaataataaaatgctaagcgaaggacagatcacgaaagaagaacatagaaagatacaacagaagatttccaagattgacgcttcgtgaatatcgtagtaaaataataatgactataatgacggaagcggtgtgatttcaaaatggaagatttctataaaatcaaagaagctctcaagattatgccgattacgacgtccgtatcagactaacgcttatccatggagtcatgaaattcccatccagatcaatatatgtttcttttcactgaattagaaaattcaaaatggaagaatagcctcgcgtcaagaacatatgctataatagaggagatagaatacgtctcgagagatcatgaaagcatggtctcttatttttatatctaaaaaaggaggaatgctcatgagtattacaccggagcagcttatcgaaaagtttcaatatgctctcgacaataattggggatacattcttggaaaagctggcggcgaatggacacaaaaagatcaagataataccaagaggaatcgtcgactgcacgatcaaacatcgatcgaagcttggctgccttcttcattata

SEQ ID NO: 2313 - DNA, 966 bp, unidentified
  source 1..966: mol_type = unassigned DNA; note = Bacteriophage uvig_593892 from the Index of /pub/databases/metagenomics/genome_sets/gut_phage_database (ebi.ac.uk)
aagaaaaaacgcaaggtggagggagctgataagcgcaccgccgatggttccgagttcgaaagccccaagaagaagaggaaagtctagttctgcagagggtgatgccattcgacgaacttgtttattgcagcttataatggttacaaataaagcaatagcatcacaaatttcacaaataaagcatttttttcactgcattctagttgtggtttgtccaaactcatcaatgtatcttagtaccgcattcatttcagtgagagcttactcatcagagttcgtatgatgcgtggaagtgcggcggcatgtggtctcttgagtaaatggaaaccttgatcccgcggaacattgaaatcgttggcatttgatcaactcctttgttgtaactataatatagcgtattcgcgcttaaatgtcaatagcgaatttgctattgacttgcgggcatcttgcacaaaatatcctgttactttttgtgcacattgcgcccgctctgagatggtacaatctgtgtgataggaggttatccaaatgcccgattgtttgtatttgcgtaagtcccgcgttgatatggaggcggagacgtccgtatcagactaacgcttatccatacggctccgatctctctctaaccctcttcccgctcgtgccggattctgactgataattccgtggagcggattcattcgcgccacggaattatcaatgttgcatatgttacaattaagcaccggagccatgcagttggctccggtgctgtctcttttactctcctccggccacacatcggtaatatgccgctgtcttgcgctccggcccgcccgcgtccttgtcaaacaaaaacgcctttgcgagatcggtgtaaaactccgtgtgatccagcccgtactttttggccacgccggagtagtggaatcgtcgactgcacgatcaaacatcgatcgaagctttatgcgaattagccagcta

SEQ ID NO: 2314 - DNA, 966 bp, unidentified
  source 1..966: mol_type = unassigned DNA; note = Bacteriophage uvig_36383 from the Index of /pub/databases/metagenomics/genome_sets/gut_phage_database (ebi.ac.uk)
aagaaaaaacgcaaggtggagggagctgataagcgcaccgccgatggttccgagttcgaaagccccaagaagaagaggaaagtctagttctgcagagggtgatgccattcgacgaacttgtttattgcagcttataatggttacaaataaagcaatagcatcacaaatttcacaaataaagcatttttttcactgcattctagttgtggtttgtccaaactcatcaatgtatcttagtaccgcattcatttcagtgagagcttactcatcagagttcgggtactgccccggttcaaagcaaattccggaatcaattctatatgctctaatctgtgatgtacttaaattggatgaatttgatgcggctgtatttcgggataatattcaccatattgtgattccgaaaccgtttgaggtgcagtttttctttcacgatggaacatctgatatacggcattggaagtacccatcaagggcagaaagttggacagaggaaatgaaacaagccgcacgagaaaggaatcagaaatgggtcgaaaagtaactgtaataccgccaacaatcagtctgcaaacgcagacgtccgtatcagactaacgcttatccataaaagggagaattgcaatttcggtttaaaaacggtactgaaataacagtttgattctgaatcgcagcattattaatttttcacataaaacgaaaagcagatttgtaacattacacaaatctgcttttttgtcttgactttgcgagaaaaatagtgtaatatagattacaagcaaaacgaatgaatccggtgttccgggtttgtcaaaggcagtggttacccactgcacaccctttcggtactgtttgcacaccccctgcaaagggagtgcatgattgtatcaaaggttaagtgtttttccggaatcgtcgactgcacgatcaaacatcgatcgaagctgctgatgattaccgcaccta

SEQ ID NO: 2315 - DNA, 966 bp, unidentified
  source 1..966: mol_type = unassigned DNA; note = Bacteriophage uvig_384338 from the Index of /pub/databases/metagenomics/genome_sets/gut_phage_database (ebi.ac.uk)
aagaaaaaacgcaaggtggagggagctgataagcgcaccgccgatggttccgagttcgaaagccccaagaagaagaggaaagtctagttctgcagagggtgatgccattcgacgaacttgtttattgcagcttataatggttacaaataaagcaatagcatcacaaatttcacaaataaagcatttttttcactgcattctagttgtggtttgtccaaactcatcaatgtatcttagtaccgcattcatttcagtgagagcttactcatcagagttcgttcagaccgccgcaatcggtctgatggccggtgccatgagcgatgacccagacgccaggaacaacgcgctggaaaccacgattcagcagattaacgatgcaaccgagtacttgaacgatgcgaccgccgcaatcaacaggcttccggtaaaaacatcccagcagtagcagatacaaaatgccccggtgccactccgccaagactgcacaccggggcttccaacctcctacggaaaggagattcacccattatgtcacaagcaatcgccggtacggcggtgatatacgcgcgcttctcgtggacgtccgtatcagactaacgcttatccatcgaggcttacgctctcacgggttcgtacaaaattcgaatggtgcccgaggtgagagtcgaactcacacgccctcgcgggcggaggattttgagtcccctgcgtctgccattccgccactcgggcataaataaatgcgctgggctatggtaccacagcccagcgcgcgcatcaaagctgaaatgaatcagttacgccttgttgacggagccgaactcctccatgagctccttggtgcgagccacgatggcctcgcgaccgggcttgagcaccttgcgggggtcgaagcccttgccctcgagggaatcgtcgactgcacgatcaaacatcgatcgaagctattgtcgcgcaactgcgtta

SEQ ID NO: 2316 - DNA, 966 bp, unidentified
  source 1..966: mol_type = unassigned DNA; note = Bacteriophage uvig_329211 from the Index of /pub/databases/metagenomics/genome_sets/gut_phage_database (ebi.ac.uk)
aagaaaaaacgcaaggtggagggagctgataagcgcaccgccgatggttccgagttcgaaagccccaagaagaagaggaaagtctagttctgcagagggtgatgccattcgacgaacttgtttattgcagcttataatggttacaaataaagcaatagcatcacaaatttcacaaataaagcatttttttcactgcattctagttgtggtttgtccaaactcatcaatgtatcttagtaccgcattcatttcagtgagagcttactcatcagagttcgtgccagctattccggcgcgccatccgcagccgatgccaaggccacagtcgataaagtacaagcatggattagttaaccgtttttcgtagtaacaaaaaaattccccggccatcgtcgcgacacgatgccggggatacgcaggacgccatttcctgcgcagatgtaaaacacgcttgaaagggtccgtgtttactgtttcattatagcatacacggccctaacgtagctatacgaaaggactgaaatttatatggaagaaagagcaaaagccgtcatctatgcccgcttttcatcggataagacgtccgtatcagactaacgcttatccattcgaaccttcgcacccggttccggagaccggtgctctatcccctgagctataggcgcaagtaagtggtgacccagtagggattcgaaccctagacccacagcttagaaggctgttgctctatccagctgagctactgagtctcaaaaaatggagcgggtgatgggaatcgaacccacataaccagcttggaaggctggcgctctaccactgagctacacccgcatcggtcggtaatggtcggagcagcaggatttgaacctgcgaccccctggtcccaagccaggtgcgctaccaaactgggaatcgtcgactgcacgatcaaacatcgatcgaagctcttgactgacatcctgttcg

SEQ ID NO: 2317 - DNA, 966 bp, unidentified
  source 1..966: mol_type = unassigned DNA; note = Bacteriophage uvig_163634 from the Index of /pub/databases/metagenomics/genome_sets/gut_phage_database (ebi.ac.uk)
aagaaaaaacgcaaggtggagggagctgataagcgcaccgccgatggttccgagttcgaaagccccaagaagaagaggaaagtctagttctgcagagggtgatgccattcgacgaacttgtttattgcagcttataatggttacaaataaagcaatagcatcacaaatttcacaaataaagcatttttttcactgcattctagttgtggtttgtccaaactcatcaatgtatcttagtaccgcattcatttcagtgagagcttactcatcagagttcgcttgaactggttatgactgcccacgacattgactaagtaccacccatcatccttgagcgccttgatgacttctcttgacgagtagcttctcatgtcggcttccctcctgacatgattagcataacacatagtattatatttgtcaatcggcaattacgaatatttctatatttgttttttgatttcagcataacaaaagctgccctgcaccgattgctcagggcaattatgaaagaaggtgttaatcaaaatgtggatgcttcccccaatgtccgtcgatgacatcataatgtacctccggacgtccgtatcagactaacgcttatccatgccgatttggaaacccagagccactggagttggagcttcaattcaaggtctgatctctcccctgcctgctctggggatagtgttgcagccatatctatcatggaagacagagaatatcccccggccttccttgtagaaggccgggggatggtttactcagtaattgtcgcttctacccgccgcacggcgtcggcggtggattccgcagtcagcggctttttaaatgcctcattaaattccgctacagccgcctcaatcagaatctgcatttcttcggcgtcaaaatcaatacccttcttcggaatcgtcgactgcacgatcaaacatcgatcgaagctcgatacgtcgtgtgagcgta

SEQ ID NO: 2318 - DNA, 966 bp, unidentified
  source 1..966: mol_type = unassigned DNA; note = Bacteriophage uvig_351740 from the Index of /pub/databases/metagenomics/genome_sets/gut_phage_database (ebi.ac.uk)
aagaaaaaacgcaaggtggagggagctgataagcgcaccgccgatggttccgagttcgaaagccccaagaagaagaggaaagtctagttctgcagagggtgatgccattcgacgaacttgtttattgcagcttataatggttacaaataaagcaatagcatcacaaatttcacaaataaagcatttttttcactgcattctagttgtggtttgtccaaactcatcaatgtatcttagtaccgcattcatttcagtgagagcttactcatcagagttcgaaacaggtgataatcttaaggtggagattcgattcagatttgagttaaaatagtaaaaaatcagtacaaatagtaaatgactgttatgtgctgatttttttgtttccttattatatatagaagtgtccatattaataattaccgtggggggattgttaatatggacactttttaagatataggaaaaactgcgatattacaggatatcagagaaatatatcattttttataaaaaagattaataaaagtattgacatagtgtgcacactatgataatatataattgtaaggaggacaagcgacgtccgtatcagactaacgcttatccatgattgctgatgaaatggggtatgaacgtacatacccgtcaaagcttgtaaagagttacctgaggaggaatgaaaatgagtaatatgcacataagagctgtaatagaatatcaaaaagaggataaaccgcgtgtaatggataagccgattatagttacatacacaagcacaggagaaaagaagcttaaagagacaattgagagtattgcctcatcaaaaaacagcagtaaagaacgaagaggttttcttaaatgatttggaatacagcactgtacctgagactgtcaaatgatgatggcgaggaatcgtcgactgcacgatcaaacatcgatcgaagctaacagtagctgtaagagcag

SEQ ID NO: 2319 - DNA, 966 bp, unidentified
  source 1..966: mol_type = unassigned DNA
aagaaaaaacgcaaggtggagggagctgataagcgcaccgccgatggttccgagttcgaaagccccaagaagaagaggaaagtctagttctgcagagggtgatgccattcgacgaacttgtttattgcagcttataatggttacaaataaagcaatagcatcacaaatttcacaaataaagcatttttttcactgcattctagttgtggtttgtccaaactcatcaatgtatcttagtaccgcattcatttcagtgagagcttactcatcagagttcgatgagtgatttaaccaatcatacccacggaggaaataattgagtatcacgttatcaggaggaaaaattttggaacaaacagttgtaaaatatagtctgcagttatcaatgcttaattttttatactctaaagaattgttatctaaaaatgaatatgaaaaaatcagaaacagactgcgtattgagtacacaaaatagctgacctttttattagaacgcggtaatatagaatcaaaaggaggggtttcagtatgaaaacaaataatgttgaaataataaaagctgattctttagttcgacggacgtccgtatcagactaacgcttatccatgagtgtgttgctctgcttgtaaaagcttagaaacctttgaacgaaagggataatgaaagccttgattgcaaggctttttgctttatggtgggtaagtatcagagtgagaaaatttttggaatgagtagaagtgatagctagaaattatcagtttctatttccatttaccctgtgggtacgtgtttgtttccattgacaaggagtttgtgggaatagaaatgtacccaccttgtttgaatcaagtgaagtgtagttgaaggaaatctgttgaaagcaatacttcattttaccgaataagtaggaatcgtcgactgcacgatcaaacatcgatcgaagcttagaggagacggcctcaacg

SEQ ID NO: 2320 - DNA, 966 bp, unidentified
  source 1..966: mol_type = unassigned DNA; note = Bacteriophage uvig_587893 from the Index of /pub/databases/metagenomics/genome_sets/gut_phage_database (ebi.ac.uk)
aagaaaaaacgcaaggtggagggagctgataagcgcaccgccgatggttccgagttcgaaagccccaagaagaagaggaaagtctagttctgcagagggtgatgccattcgacgaacttgtttattgcagcttataatggttacaaataaagcaatagcatcacaaatttcacaaataaagcatttttttcactgcattctagttgtggtttgtccaaactcatcaatgtatcttagtaccgcattcatttcagtgagagcttactcatcagagttcgacagcatggcgcgcagcgaggcggcgcagatcgccgtcaactacggcggcaaggtggaggacggcgtcaccaaaaagacaaactttctcgtcctcggcagcaccgattactgctcctccctcaacggcgccaagagcagcaagcaactcaaggccgaaaagctcatcgcggaagggcaggaccttgtcattataaccgaggcggaatttttggaaatgacgctctattttaatccggaaaacgaagacttatgaacgccgtcatatatgcgcgctactcctcctacaaccagaccgagcggacgtccgtatcagactaacgcttatccatttatttgtttcggctgtttcggattattcattccccttcatcaggacggctaggccgtccttttgtttttacaggagttttttaaaaaaattagttttcccccttgacaaaacggcaaaaatcgtgtattgttgatatgcaacaaaaaacacacagaacgcagaaagggccccctatggacgacgtattatcatttcccagcgataaggcttacagcaactacccccgcatcaacatcgacggcgactgcaacgaccttgcaaaatggtttgagcagcataaggagatcgaccgccgcatggaatcgtcgactgcacgatcaaacatcgatcgaagctagcaacagttgcgtcgatcg

SEQ ID NO: 2321 - DNA, 966 bp, unidentified
  source 1..966: mol_type = unassigned DNA; note = Bacteriophage uvig_195542 from the Index of /pub/databases/metagenomics/genome_sets/gut_phage_database (ebi.ac.uk)
aagaaaaaacgcaaggtggagggagctgataagcgcaccgccgatggttccgagttcgaaagccccaagaagaagaggaaagtctagttctgcagagggtgatgccattcgacgaacttgtttattgcagcttataatggttacaaataaagcaatagcatcacaaatttcacaaataaagcatttttttcactgcattctagttgtggtttgtccaaactcatcaatgtatcttagtaccgcattcatttcagtgagagcttactcatcagagttcgatactaatgcactttcgctcccagaaaaagtctgccaacgatatccactttgacgagcctgttgactccgataaggacggcaatcagctttgccttatcgactaagctataatgtcattattggggaatttttttacgagggaggatattttatgtttcagatacttgtggtggaggacgacgcaagccttagaaagctcatgtctgccgcacttaaacagcatggctacgtgacttttcttgcaaatgacggtctggaggctttggacgttcttgaaaaaacgaatatagaccttataagacgtccgtatcagactaacgcttatccatggttactgggagggtttcgaaagggaaatcaaatgggggcagttctgacgaaccaaaaaaggttctgagagtttgaattaaggctcaactcttgtaataacgtcttttattaatgtaaccacccaactatacatatgataataatagtcaagtattaattttctcaatacttgactattgtttattgacttacaccatttattgtggtatgctgtatgatacccaataaaataaaaaaggagaacctcatatgagtacaagcaatactgactgcgataatcggaagtacgccatatatgcggaatcgtcgactgcacgatcaaacatcgatcgaagctcagccgagttgaatcgttcg

SEQ ID NO: 2322 - DNA, 966 bp, unidentified
  source 1..966: mol_type = unassigned DNA; note = Bacteriophage uvig_40909 from the Index of /pub/databases/metagenomics/genome_sets/gut_phage_database (ebi.ac.uk)
aagaaaaaacgcaaggtggagggagctgataagcgcaccgccgatggttccgagttcgaaagccccaagaagaagaggaaagtctagttctgcagagggtgatgccattcgacgaacttgtttattgcagcttataatggttacaaataaagcaatagcatcacaaatttcacaaataaagcatttttttcactgcattctagttgtggtttgtccaaactcatcaatgtatcttagtaccgcattcatttcagtgagagcttactcatcagagttcgccgcaaggcaatcgaggcctccggcggtgccgtcaccgaccccgttgccctctccgacctcatggctatgcagggccagcttaaaaacgctgtggccgctctgcttgacaagctcatgcaggccgacatggaaatcgcgttcaacatcaagagagacgaagatgccgcattcaaaagcgggtcggcaatgtgatctacgtggactttcgcccctccccgtgaggggcgtttcctttggaggtgaatccctatgcgaaattatccacccctgtcctccgccgaggaatactgtatgtatctgacgtccgtatcagactaacgcttatccatacttcgagctgctgctgtaccccaagctgccgccctccggcctcggagaataacggaaataattaaagccgtccatttcgggcggcttttctttgtgacaaccttgcaggtgtgatttatcattgctgcaaggttatcacaaataagcctaaaaaaatcgcgcccggctgtcctgcgaaaagtgtccggcgcaaaagccaagaatctgatatgcgcgtgagattttaccaacggccatgtctatcaggttccgggtctccgggtctgacacctctgcgagggctgctttgaacgcctgctggaatcgtcgactgcacgatcaaacatcgatcgaagctaggccttccaccaaccttcg

SEQ ID NO: 2323 - DNA, 30 bp, synthetic construct
  source 1..30: mol_type = other DNA
gccaccatgcccaagaagaagcggaaggtt
